United States Patent Application Publication US 2026/0284224 A1, published September 24, 2026 (application 19/473,038).

The application's sequence listing, which the Patent Office published only in electronic form, follows.

SEQUENCE LISTING (6405 sequences)

SEQ ID NO: 1 - protein, 743 aa, synthetic construct
MAADGYLPDWLEDNLSEGIREWWALKPGAPQPKANQQHQDNARGLVLPGYKYLGPGNGLDKGEPVNAADAAALEHDKAYDQQLKAGDNPYLKYNHADAEFQERLKEDTSFGGNLGRAVFQAKKRLLEPLGLVEEAAKTAPGKKRPVEQSPQEPDSSAGIGKSGAQPAKKRLNFGQTGDTESVPDPQPIGEPPAAPSGVGSLTMASGGGAPVADNNEGADGVGSSSGNWHCDSQWLGDRVITTSTRTWALPTYNNHLYKQISNSTSGGSSNDNAYFGYSTPWGYFDFNRFHCHFSPRDWQRLINNNWGFRPKRLNFKLFNIQVKEVTDNNGVKTIANNLTSTVQVFTDSDYQLPYVLGSAHEGCLPPFPADVFMIPQYGYLTLNDGSQAVGRSSFYCLEYFPSQMLRTGNNFQFSYEFENVPFHSSYAHSQSLDRLMNPLIDQYLYYLSKTINGSGQNQQTLKFSVAGPSNMAVQGRNYIPGPSYRQQRVSTTVTQNNNSEFAWPGASSWALNGRNSLMNPGPAMASHKEGEDRFFPLSGSLIFGKQGTGRDNVDADKVMITNEEEIKTTNPVATESYGQVATNHQSDGTLAVPFKAQAQTGWVQNQGILPGMVWQDRDVYLQGPIWAKIPHTDGNFHPSPLMGGFGMKHPPPQILIKNTPVPADPPTAFNKDKLNSFITQYSTGQVSVEIEWELQKENSKRWNPEIQYTSNYYKSNNVEFAVNTEGVYSEPRPIGTRYLTRNL

SEQ ID NO: 2 - protein, 6 aa, synthetic construct
HDSPHK

SEQ ID NO: 3 - protein, 4 aa, synthetic construct
SPHP

SEQ ID NO: 4 - protein, 4 aa, synthetic construct
SPHY

SEQ ID NO: 5 - protein, 4 aa, synthetic construct
SPHG

SEQ ID NO: 6 - protein, 4 aa, synthetic construct
SPHW

SEQ ID NO: 7 - protein, 4 aa, synthetic construct
SPHT

SEQ ID NO: 8 - protein, 4 aa, synthetic construct
SPHA

SEQ ID NO: 9 - protein, 4 aa, synthetic construct
SPHN

SEQ ID NO: 10 - protein, 4 aa, synthetic construct
SPHL

SEQ ID NO: 11 - protein, 736 aa, synthetic construct
MAADGYLPDWLEDNLSEGIREWWALKPGAPQPKANQQHQDNARGLVLPGYKYLGPGNGLDKGEPVNAADAAALEHDKAYDQQLKAGDNPYLKYNHADAEFQERLKEDTSFGGNLGRAVFQAKKRLLEPLGLVEEAAKTAPGKKRPVEQSPQEPDSSAGIGKSGAQPAKKRLNFGQTGDTESVPDPQPIGEPPAAPSGVGSLTMASGGGAPVADNNEGADGVGSSSGNWHCDSQWLGDRVITTSTRTWALPTYNNHLYKQISNSTSGGSSNDNAYFGYSTPWGYFDFNRFHCHFSPRDWQRLINNNWGFRPKRLNFKLFNIQVKEVTDNNGVKTIANNLTSTVQVFTDSDYQLPYVLGSAHEGCLPPFPADVFMIPQYGYLTLNDGSQAVGRSSFYCLEYFPSQMLRTGNNFQFSYEFENVPFHSSYAHSQSLDRLMNPLIDQYLYYLSRTINGSGQNQQTLKFSVAGPSNMAVQGRNYIPGPSYRQQRVSTTVTQNNNSEFAWPGASSWALNGRNSLMNPGPAMASHKEGEDRFFPLSGSLIFGKQGTGRDNVDADKVMITNEEEIKTTNPVATESYGQVATNHQSAQAQAQTGWVQNQGILPGMVWQDRDVYLQGPIWAKIPHTDGNFHPSPLMGGFGMKHPPPQILIKNTPVPADPPTAFNKDKLNSFITQYSTGQVSVEIEWELQKENSKRWNPEIQYTSNYYKSNNVEFAVNTEGVYSEPRPIGTRYLTRNL

SEQ ID NO: 12 - protein, 4 aa, synthetic construct
SPHQ

SEQ ID NO: 13 - protein, 4 aa, synthetic construct
SPHM

SEQ ID NO: 14 - protein, 4 aa, synthetic construct
SPHI

SEQ ID NO: 15 - protein, 4 aa, synthetic construct
SPHV

SEQ ID NO: 16 - protein, 4 aa, synthetic construct
SPHH

SEQ ID NO: 17 - protein, 4 aa, synthetic construct
SSPH

SEQ ID NO: 18 - protein, 4 aa, synthetic construct
MSPH

SEQ ID NO: 19 - protein, 4 aa, synthetic construct
TSPH

SEQ ID NO: 20 - protein, 4 aa, synthetic construct
GSPH

SEQ ID NO: 21 - protein, 4 aa, synthetic construct
ASPH

SEQ ID NO: 22 - protein, 4 aa, synthetic construct
LSPH

SEQ ID NO: 23 - protein, 4 aa, synthetic construct
NSPH

SEQ ID NO: 24 - protein, 4 aa, synthetic construct
RSPH

SEQ ID NO: 25 - protein, 4 aa, synthetic construct
FSPH

SEQ ID NO: 26 - protein, 4 aa, synthetic construct
YSPH

SEQ ID NO: 27 - protein, 4 aa, synthetic construct
QSPH

SEQ ID NO: 28 - protein, 4 aa, synthetic construct
VSPH

SEQ ID NO: 29 - protein, 4 aa, synthetic construct
KSPH

SEQ ID NO: 30 - protein, 4 aa, synthetic construct
ISPH

SEQ ID NO: 31 - protein, 4 aa, synthetic construct
HSPH

SEQ ID NO: 32 - protein, 5 aa, synthetic construct
RSSPH

SEQ ID NO: 33 - protein, 5 aa, synthetic construct
RMSPH

SEQ ID NO: 34 - protein, 5 aa, synthetic construct
RTSPH

SEQ ID NO: 35 - protein, 5 aa, synthetic construct
WGSPH

SEQ ID NO: 36 - protein, 742 aa, synthetic construct
MAADGYLPDWLEDNLSEGIREWWALKPGAPQPKANQQHQDNARGLVLPGYKYLGPGNGLDKGEPVNAADAAALEHDKAYDQQLKAGDNPYLKYNHADAEFQERLKEDTSFGGNLGRAVFQAKKRLLEPLGLVEEAAKTAPGKKRPVEQSPQEPDSSAGIGKSGAQPAKKRLNFGQTGDTESVPDPQPIGEPPAAPSGVGSLTMASGGGAPVADNNEGADGVGSSSGNWHCDSQWLGDRVITTSTRTWALPTYNNHLYKQISNSTSGGSSNDNAYFGYSTPWGYFDFNRFHCHFSPRDWQRLINNNWGFRPKRLNFKLFNIQVKEVTDNNGVKTIANNLTSTVQVFTDSDYQLPYVLGSAHEGCLPPFPADVFMIPQYGYLTLNDGSQAVGRSSFYCLEYFPSQMLRTGNNFQFSYEFENVPFHSSYAHSQSLDRLMNPLIDQYLYYLSKTERVSGSPHSKAQNQQTLKFSVAGPSNMAVQGRNYIPGPSYRQQRVSTTVTQNNNSEFAWPGASSWALNGRNSLMNPGPAMASHKEGEDRFFPLSGSLIFGKQGTGRDNVDADKVMITNEEEIKTTNPVATESYGQVATNHQSAQAQAQTGWVQNQGILPGMVWQDRDVYLQGPIWAKIPHTDGNFHPSPLMGGFGMKHPPPQILIKNTPVPADPPTAFNKDKLNSFITQYSTGQVSVEIEWELQKENSKRWNPEIQYTSNYYKSNNVEFAVNTEGVYSEPRPIGTRYLTRNL

SEQ ID NO: 37 - protein, 5 aa, synthetic construct
RASPH

SEQ ID NO: 38 - protein, 5 aa, synthetic construct
RLSPH

SEQ ID NO: 39 - protein, 742 aa, synthetic construct
MAADGYLPDWLEDNLSEGIREWWALKPGAPQPKANQQHQDNARGLVLPGYKYLGPGNGLDKGEPVNAADAAALEHDKAYDQQLKAGDNPYLKYNHADAEFQERLKEDTSFGGNLGRAVFQAKKRLLEPLGLVEEAAKTAPGKKRPVEQSPQEPDSSAGIGKSGAQPAKKRLNFGQTGDTESVPDPQPIGEPPAAPSGVGSLTMASGGGAPVADNNEGADGVGSSSGNWHCDSQWLGDRVITTSTRTWALPTYNNHLYKQISNSTSGGSSNDNAYFGYSTPWGYFDFNRFHCHFSPRDWQRLINNNWGFRPKRLNFKLFNIQVKEVTDNNGVKTIANNLTSTVQVFTDSDYQLPYVLGSAHEGCLPPFPADVFMIPQYGYLTLNDGSQAVGRSSFYCLEYFPSQMLRTGNNFQFSYEFENVPFHSSYAHSQSLDRLMNPLIDQYLYYLSKTEKMSGSPHSKAQNQQTLKFSVAGPSNMAVQGRNYIPGPSYRQQRVSTTVTQNNNSEFAWPGASSWALNGRNSLMNPGPAMASHKEGEDRFFPLSGSLIFGKQGTGRDNVDADKVMITNEEEIKTTNPVATESYGQVATNHQSAQAQAQTGWVQNQGILPGMVWQDRDVYLQGPIWAKIPHTDGNFHPSPLMGGFGMKHPPPQILIKNTPVPADPPTAFNKDKLNSFITQYSTGQVSVEIEWELQKENSKRWNPEIQYTSNYYKSNNVEFAVNTEGVYSEPRPIGTRYLTRNL

SEQ ID NO: 40 - protein, 5 aa, synthetic construct
RNSPH

SEQ ID NO: 41 - protein, 5 aa, synthetic construct
ARSPH

SEQ ID NO: 42 - protein, 5 aa, synthetic construct
RFSPH

SEQ ID NO: 43 - protein, 5 aa, synthetic construct
LGSPH

SEQ ID NO: 44 - protein, 5 aa, synthetic construct
TTSPH

SEQ ID NO: 45 - protein, 5 aa, synthetic construct
SRSPH

SEQ ID NO: 46 - protein, 5 aa, synthetic construct
RGSPH

SEQ ID NO: 47 - protein, 5 aa, synthetic construct
WTSPH

SEQ ID NO: 48 - protein, 5 aa, synthetic construct
PFSPH

SEQ ID NO: 49 - protein, 5 aa, synthetic construct
HRSPH

SEQ ID NO: 50 - protein, 5 aa, synthetic construct
VYSPH

SEQ ID NO: 51 - protein, 742 aa, synthetic construct
MAADGYLPDWLEDNLSEGIREWWALKPGAPQPKANQQHQDNARGLVLPGYKYLGPGNGLDKGEPVNAADAAALEHDKAYDQQLKAGDNPYLKYNHADAEFQERLKEDTSFGGNLGRAVFQAKKRLLEPLGLVEEAAKTAPGKKRPVEQSPQEPDSSAGIGKSGAQPAKKRLNFGQTGDTESVPDPQPIGEPPAAPSGVGSLTMASGGGAPVADNNEGADGVGSSSGNWHCDSQWLGDRVITTSTRTWALPTYNNHLYKQISNSTSGGSSNDNAYFGYSTPWGYFDFNRFHCHFSPRDWQRLINNNWGFRPKRLNFKLFNIQVKEVTDNNGVKTIANNLTSTVQVFTDSDYQLPYVLGSAHEGCLPPFPADVFMIPQYGYLTLNDGSQAVGRSSFYCLEYFPSQMLRTGNNFQFSYEFENVPFHSSYAHSQSLDRLMNPLIDQYLYYLSKTINGHDSPHSKAQNLQTLKFSVAGPSNMAVQGRNYIPGPSYRQQRVSTTVTQNNNSEFAWPGASSWALNGRNSLMNPGPAMASHKEGEDRFFPLSGSLIFGKQGTGRDNVDADKVMITNEEEIKTTNPVATESYGQVATNHQSAQAQAQTGWVQNQGILPGMVWQDRDVYLQGPIWAKIPHTDGNFHPSPLMGGFGMKHPPPQILIKNTPVPADPPTAFNKDKLNSFITQYSTGQVSVEIEWELQKENSKRWNPEIQYTSNYYKSNNVEFAVNTEGVYSEPRPIGTRYLTRNL

SEQ ID NO: 52 - protein, 742 aa, synthetic construct
MAADGYLPDWLEDNLSEGIREWWALKPGAPQPKANQQHQDNARGLVLPGYKYLGPGNGLDKGEPVNAADAAALEHDKAYDQQLKAGDNPYLKYNHADAEFQERLKEDTSFGGNLGRAVFQAKKRLLEPLGLVEEAAKTAPGKKRPVEQSPQEPDSSAGIGKSGAQPAKKRLNFGQTGDTESVPDPQPIGEPPAAPSGVGSLTMASGGGAPVADNNEGADGVGSSSGNWHCDSQWLGDRVITTSTRTWALPTYNNHLYKQISNSTSGGSSNDNAYFGYSTPWGYFDFNRFHCHFSPRDWQRLINNNWGFRPKRLNFKLFNIQVKEVTDNNGVKTIANNLTSTVQVFTDSDYQLPYVLGSAHEGCLPPFPADVFMIPQYGYLTLNDGSQAVGRSSFYCLEYFPSQMLRTGNNFQFSYEFENVPFHSSYAHSQSLDRLMNPLIDQYLYYLSKTVNGHDSPHSKAQNQQTLKFSVAGPSNMAVQGRNYIPGPSYRQQRVSTTVTQNNNSEFAWPGASSWALNGRNSLMNPGPAMASHKEGEDRFFPLSGSLIFGKQGTGRDNVDADKVMITNEEEIKTTNPVATESYGQVATNHQSAQAQAQTGWVQNQGILPGMVWQDRDVYLQGPIWAKIPHTDGNFHPSPLMGGFGMKHPPPQILIKNTPVPADPPTAFNKDKLNSFITQYSTGQVSVEIEWELQKENSKRWNPEIQYTSNYYKSNNVEFAVNTEGVYSEPRPIGTRYLTRNL

SEQ ID NO: 53 - protein, 5 aa, synthetic construct
PRSPH

SEQ ID NO: 54 - protein, 5 aa, synthetic construct
LRSPH

SEQ ID NO: 55 - protein, 5 aa, synthetic construct
WRSPH

SEQ ID NO: 56 - protein, 5 aa, synthetic construct
VRSPH

SEQ ID NO: 57 - protein, 5 aa, synthetic construct
RQSPH

SEQ ID NO: 58 - protein, 5 aa, synthetic construct
GTSPH

SEQ ID NO: 59 - protein, 5 aa, synthetic construct
SVSPH

SEQ ID NO: 60 - protein, 5 aa, synthetic construct
PLSPH

SEQ ID NO: 61 - protein, 5 aa, synthetic construct
STSPH

SEQ ID NO: 62 - protein, 5 aa, synthetic construct
TLSPH

SEQ ID NO: 63 - protein, 5 aa, synthetic construct
MSSPH

SEQ ID NO: 64 - protein, 5 aa, synthetic construct
QRSPH

SEQ ID NO: 65 - protein, 5 aa, synthetic construct
AKSPH

SEQ ID NO: 66 - protein, 5 aa, synthetic construct
ALSPH

SEQ ID NO: 67 - protein, 5 aa, synthetic construct
IRSPH

SEQ ID NO: 68 - protein, 5 aa, synthetic construct
RVSPH

SEQ ID NO: 69 - protein, 5 aa, synthetic construct
RISPH

SEQ ID NO: 70 - protein, 5 aa, synthetic construct
YRSPH

SEQ ID NO: 71 - protein, 5 aa, synthetic construct
TRSPH

SEQ ID NO: 72 - protein, 5 aa, synthetic construct
RYSPH

SEQ ID NO: 73 - protein, 5 aa, synthetic construct
GASPH

SEQ ID NO: 74 - protein, 5 aa, synthetic construct
ITSPH

SEQ ID NO: 75 - protein, 5 aa, synthetic construct
GHSPH

SEQ ID NO: 76 - protein, 5 aa, synthetic construct
SKSPH

SEQ ID NO: 77 - protein, 5 aa, synthetic construct
KLSPH

SEQ ID NO: 78 - protein, 5 aa, synthetic construct
SSPHP

SEQ ID NO: 79 - protein, 5 aa, synthetic construct
SSPHY

SEQ ID NO: 80 - protein, 5 aa, synthetic construct
MSPHG

SEQ ID NO: 81 - protein, 5 aa, synthetic construct
MSPHP

SEQ ID NO: 82 - protein, 5 aa, synthetic construct
TSPHP

SEQ ID NO: 83 - protein, 5 aa, synthetic construct
GSPHS

SEQ ID NO: 84 - protein, 5 aa, synthetic construct
ASPHP

SEQ ID NO: 85 - protein, 5 aa, synthetic construct
LSPHY

SEQ ID NO: 86 - protein, 5 aa, synthetic construct
MSPHS

SEQ ID NO: 87 - protein, 5 aa, synthetic construct
SSPHW

SEQ ID NO: 88 - protein, 5 aa, synthetic construct
ASPHY

SEQ ID NO: 89 - protein, 5 aa, synthetic construct
NSPHG

SEQ ID NO: 90 - protein, 5 aa, synthetic construct
RSPHY

SEQ ID NO: 91 - protein, 5 aa, synthetic construct
LSPHT

SEQ ID NO: 92 - protein, 5 aa, synthetic construct
SSPHA

SEQ ID NO: 93 - protein, 5 aa, synthetic construct
FSPHS

SEQ ID NO: 94 - protein, 5 aa, synthetic construct
LSPHG

SEQ ID NO: 95 - protein, 5 aa, synthetic construct
TSPHS

SEQ ID NO: 96 - protein, 5 aa, synthetic construct
RSPHN

SEQ ID NO: 97 - protein, 5 aa, synthetic construct
GSPHL

SEQ ID NO: 98 - protein, 5 aa, synthetic construct
FSPHG

SEQ ID NO: 99 - protein, 5 aa, synthetic construct
RSPHP

SEQ ID NO: 100 - protein, 5 aa, synthetic construct
YSPHS

SEQ ID NO: 101 - protein, 5 aa, synthetic construct
MSPHQ

SEQ ID NO: 102 - protein, 5 aa, synthetic construct
RSPHG

SEQ ID NO: 103 - protein, 5 aa, synthetic construct
RSPHS

SEQ ID NO: 104 - protein, 5 aa, synthetic construct
GSPHQ

SEQ ID NO: 105 - protein, 5 aa, synthetic construct
TSPHL

SEQ ID NO: 106 - protein, 5 aa, synthetic construct
RSPHM

SEQ ID NO: 107 - protein, 5 aa, synthetic construct
QSPHI

SEQ ID NO: 108 - protein, 5 aa, synthetic construct
TSPHA

SEQ ID NO: 109 - protein, 5 aa, synthetic construct
VSPHQ

SEQ ID NO: 110 - protein, 5 aa, synthetic construct
LSPHA

SEQ ID NO: 111 - protein, 5 aa, synthetic construct
RSPHA

SEQ ID NO: 112 - protein, 5 aa, synthetic construct
RSPHT

SEQ ID NO: 113 - protein, 5 aa, synthetic construct
LSPHS

SEQ ID NO: 114 - protein, 5 aa, synthetic construct
SSPHS

SEQ ID NO: 115 - protein, 5 aa, synthetic construct
TSPHV

SEQ ID NO: 116 - protein, 5 aa, synthetic construct
QSPHG

SEQ ID NO: 117 - protein, 5 aa, synthetic construct
KSPHW

SEQ ID NO: 118 - protein, 5 aa, synthetic construct
NSPHH

SEQ ID NO: 119 - protein, 5 aa, synthetic construct
LSPHV

SEQ ID NO: 120 - protein, 5 aa, synthetic construct
ASPHN

SEQ ID NO: 121 - protein, 5 aa, synthetic construct
MSPHV

SEQ ID NO: 122 - protein, 5 aa, synthetic construct
VSPHP

SEQ ID NO: 123 - protein, 5 aa, synthetic construct
LSPHH

SEQ ID NO: 124 - protein, 5 aa, synthetic construct
VSPHA

SEQ ID NO: 125 - protein, 5 aa, synthetic construct
ISPHL

SEQ ID NO: 126 - protein, 5 aa, synthetic construct
RSPHQ

SEQ ID NO: 127 - protein, 5 aa, synthetic construct
YSPHT

SEQ ID NO: 128 - protein, 5 aa, synthetic construct
LSPHL

SEQ ID NO: 129 - protein, 5 aa, synthetic construct
ASPHS

SEQ ID NO: 130 - protein, 5 aa, synthetic construct
HSPHG

SEQ ID NO: 131 - protein, 5 aa, synthetic construct
KSPHS

SEQ ID NO: 132 - protein, 5 aa, synthetic construct
TSPHT

SEQ ID NO: 133 - protein, 5 aa, synthetic construct
TSPHW

SEQ ID NO: 134-136 - skipped (3 entries)

SEQ ID NO: 137 - DNA, 2211 bp, synthetic construct
  source 1..2211: mol_type = other DNA
atggctgccgatggttatcttccagattggctcgaggacaaccttagtgaaggaattcgcgagtggtgggctttgaaacctggagcccctcaacccaaggcaaatcaacaacatcaagacaacgctcgaggtcttgtgcttccgggttacaaataccttggacccggcaacggactcgacaagggggagccggtcaacgcagcagacgcggcggccctcgagcacgacaaggcctacgaccagcagctcaaggccggagacaacccgtacctcaagtacaaccacgccgacgccgagttccaggagcggctcaaagaagatacgtcttttgggggcaacctcgggcgagcagtcttccaggccaaaaagaggcttcttgaacctcttggtctggttgaggaagcggctaagacggctcctggaaagaagaggcctgtagagcagtctcctcaggaaccggactcctccgcgggtattggcaaatcgggtgcacagcccgctaaaaagagactcaatttcggtcagactggcgacacagagtcagtcccagaccctcaaccaatcggagaacctcccgcagccccctcaggtgtgggatctcttacaatggcttcaggtggtggcgcaccagtggcagacaataacgaaggtgccgatggagtgggtagttcctcgggaaattggcattgcgattcccaatggctgggggacagagtcatcaccaccagcacccgaacctgggccctgcccacctacaacaatcacctctacaagcaaatctccaacagcacatctggaggatcttcaaatgacaacgcctacttcggctacagcaccccctgggggtattttgacttcaacagattccactgccacttctcaccacgtgactggcagcgactcatcaacaacaactggggattccggcctaagcgactcaacttcaagctcttcaacattcaggtcaaagaggttacggacaacaatggagtcaagaccatcgccaataaccttaccagcacggtccaggtcttcacggactcagactatcagctcccgtacgtgctcgggtcggctcacgagggctgcctcccgccgttcccagcggacgttttcatgattcctcagtacgggtatctgacgcttaatgatggaagccaggccgtgggtcgttcgtccttttactgcctggaatatttcccgtcgcaaatgctaagaacgggtaacaacttccagttcagctacgagtttgagaacgtacctttccatagcagctacgctcacagccaaagcctggaccgactaatgaatccactcatcgaccaatacttgtactatctctcaaagactattaacggttctggacagaatcaacaaacgctaaaattcagtgtggccggacccagcaacatggctgtccagggaagaaactacatacctggacccagctaccgacaacaacgtgtctcaaccactgtgactcaaaacaacaacagcgaatttgcttggcctggagcttcttcttgggctctcaatggacgtaatagcttgatgaatcctggacctgctatggccagccacaaagaaggagaggaccgtttctttcctttgtctggatctttaatttttggcaaacaaggaactggaagagacaacgtggatgcggacaaagtcatgataaccaacgaagaagaaattaaaactactaacccggtagcaacggagtcctatggacaagtggccacaaaccaccagagtgcccaagcacaggcgcagaccggctgggttcaaaaccaaggaatacttccgggtatggtttggcaggacagagatgtgtacctgcaaggacccatttgggccaaaattcctcacacggacggcaactttcacccttctccgctgatgggagggtttggaatgaagcacccgcctcctcagatcctcatcaaaaacacacctgtacctgcggatcctccaacggccttcaacaaggacaagctgaactctttcatcacccagtattctactggccaagtcagcgtggagatcgagtgggagctgcagaaggaaaacagcaagcgctggaacccggagatccagtacacttccaactattacaagtctaataatgttgaatttgctgttaatactgaaggtgtatatagtgaaccccgccccattggcaccagatacctgactcgtaatctgtaa

SEQ ID NO: 138 - protein, 736 aa, synthetic construct
MAADGYLPDWLEDNLSEGIREWWALKPGAPQPKANQQHQDNARGLVLPGYKYLGPGNGLDKGEPVNAADAAALEHDKAYDQQLKAGDNPYLKYNHADAEFQERLKEDTSFGGNLGRAVFQAKKRLLEPLGLVEEAAKTAPGKKRPVEQSPQEPDSSAGIGKSGAQPAKKRLNFGQTGDTESVPDPQPIGEPPAAPSGVGSLTMASGGGAPVADNNEGADGVGSSSGNWHCDSQWLGDRVITTSTRTWALPTYNNHLYKQISNSTSGGSSNDNAYFGYSTPWGYFDFNRFHCHFSPRDWQRLINNNWGFRPKRLNFKLFNIQVKEVTDNNGVKTIANNLTSTVQVFTDSDYQLPYVLGSAHEGCLPPFPADVFMIPQYGYLTLNDGSQAVGRSSFYCLEYFPSQMLRTGNNFQFSYEFENVPFHSSYAHSQSLDRLMNPLIDQYLYYLSKTINGSGQNQQTLKFSVAGPSNMAVQGRNYIPGPSYRQQRVSTTVTQNNNSEFAWPGASSWALNGRNSLMNPGPAMASHKEGEDRFFPLSGSLIFGKQGTGRDNVDADKVMITNEEEIKTTNPVATESYGQVATNHQSAQAQAQTGWVQNQGILPGMVWQDRDVYLQGPIWAKIPHTDGNFHPSPLMGGFGMKHPPPQILIKNTPVPADPPTAFNKDKLNSFITQYSTGQVSVEIEWELQKENSKRWNPEIQYTSNYYKSNNVEFAVNTEGVYSEPRPIGTRYLTRNL

SEQ ID NO: 139-940 - skipped (802 entries)

SEQ ID NO: 941 - protein, 6 aa, synthetic construct
SPHSKA

SEQ ID NO: 942-946 - skipped (5 entries)

SEQ ID NO: 947 - protein, 6 aa, synthetic construct
SPHARM

SEQ ID NO: 948-951 - skipped (4 entries)

SEQ ID NO: 952 - protein, 6 aa, synthetic construct
SPHSLR

SEQ ID NO: 953-959 - skipped (7 entries)

SEQ ID NO: 960 - protein, 6 aa, synthetic construct
SPHSKL

SEQ ID NO: 961-965 - skipped (5 entries)

SEQ ID NO: 966 - protein, 6 aa, synthetic construct
SPHKYG

SEQ ID NO: 967-972 - skipped (6 entries)

SEQ ID NO: 973 - protein, 6 aa, synthetic construct
SPHVRG

SEQ ID NO: 974 - protein, 6 aa, synthetic construct
SPHKRG

SEQ ID NO: 975-980 - skipped (6 entries)

SEQ ID NO: 981 - protein, 742 aa, synthetic construct
MAADGYLPDWLEDNLSEGIREWWALKPGAPQPKANQQHQDNARGLVLPGYKYLGPGNGLDKGEPVNAADAAALEHDKAYDQQLKAGDNPYLKYNHADAEFQERLKEDTSFGGNLGRAVFQAKKRLLEPLGLVEEAAKTAPGKKRPVEQSPQEPDSSAGIGKSGAQPAKKRLNFGQTGDTESVPDPQPIGEPPAAPSGVGSLTMASGGGAPVADNNEGADGVGSSSGNWHCDSQWLGDRVITTSTRTWALPTYNNHLYKQISNSTSGGSSNDNAYFGYSTPWGYFDFNRFHCHFSPRDWQRLINNNWGFRPKRLNFKLFNIQVKEVTDNNGVKTIANNLTSTVQVFTDSDYQLPYVLGSAHEGCLPPFPADVFMIPQYGYLTLNDGSQAVGRSSFYCLEYFPSQMLRTGNNFQFSYEFENVPFHSSYAHSQSLDRLMNPLIDQYLYYLSKTINGSGSPHSKAQNQQTLKFSVAGPSNMAVQGRNYIPGPSYRQQRVSTTVTQNNNSEFAWPGASSWALNGRNSLMNPGPAMASHKEGEDRFFPLSGSLIFGKQGTGRDNVDADKVMITNEEEIKTTNPVATESYGQVATNHQSAQAQAQTGWVQNQGILPGMVWQDRDVYLQGPIWAKIPHTDGNFHPSPLMGGFGMKHPPPQILIKNTPVPADPPTAFNKDKLNSFITQYSTGQVSVEIEWELQKENSKRWNPEIQYTSNYYKSNNVEFAVNTEGVYSEPRPIGTRYLTRNL

SEQ ID NO: 982 - protein, 742 aa, synthetic construct
MAADGYLPDWLEDNLSEGIREWWALKPGAPQPKANQQHQDNARGLVLPGYKYLGPGNGLDKGEPVNAADAAALEHDKAYDQQLKAGDNPYLKYNHADAEFQERLKEDTSFGGNLGRAVFQAKKRLLEPLGLVEEAAKTAPGKKRPVEQSPQEPDSSAGIGKSGAQPAKKRLNFGQTGDTESVPDPQPIGEPPAAPSGVGSLTMASGGGAPVADNNEGADGVGSSSGNWHCDSQWLGDRVITTSTRTWALPTYNNHLYKQISNSTSGGSSNDNAYFGYSTPWGYFDFNRFHCHFSPRDWQRLINNNWGFRPKRLNFKLFNIQVKEVTDNNGVKTIANNLTSTVQVFTDSDYQLPYVLGSAHEGCLPPFPADVFMIPQYGYLTLNDGSQAVGRSSFYCLEYFPSQMLRTGNNFQFSYEFENVPFHSSYAHSQSLDRLMNPLIDQYLYYLSKTINGHDSPHKSGQNQQTLKFSVAGPSNMAVQGRNYIPGPSYRQQRVSTTVTQNNNSEFAWPGASSWALNGRNSLMNPGPAMASHKEGEDRFFPLSGSLIFGKQGTGRDNVDADKVMITNEEEIKTTNPVATESYGQVATNHQSAQAQAQTGWVQNQGILPGMVWQDRDVYLQGPIWAKIPHTDGNFHPSPLMGGFGMKHPPPQILIKNTPVPADPPTAFNKDKLNSFITQYSTGQVSVEIEWELQKENSKRWNPEIQYTSNYYKSNNVEFAVNTEGVYSEPRPIGTRYLTRNL

SEQ ID NO: 983-986 - skipped (4 entries)

SEQ ID NO: 987 - DNA, 1184 bp, synthetic construct
  source 1..1184: mol_type = other DNA
cgtgaggctccggtgcccgtcagtgggcagagcgcacatcgcccacagtccccgagaagttggggggaggggtcggcaattgaaccggtgcctagagaaggtggcgcggggtaaactgggaaagtgatgtcgtgtactggctccgcctttttcccgagggtgggggagaaccgtatataagtgcagtagtcgccgtgaacgttctttttcgcaacgggtttgccgccagaacacaggtaagtgccgtgtgtggttcccgcgggcctggcctctttacgggttatggcccttgcgtgccttgaattacttccacctggctgcagtacgtgattcttgatcccgagcttcgggttggaagtgggtgggagagttcgaggccttgcgcttaaggagccccttcgcctcgtgcttgagttgaggcctggcctgggcgctggggccgccgcgtgcgaatctggtggcaccttcgcgcctgtctcgctgctttcgataagtctctagccatttaaaatttttgatgacctgctgcgacgctttttttctggcaagatagtcttgtaaatgcgggccaagatctgcacactggtatttcggtttttggggccgcgggcggcgacggggcccgtgcgtcccagcgcacatgttcggcgaggcggggcctgcgagcgcggccaccgagaatcggacgggggtagtctcaagctggccggcctgctctggtgcctggcctcgcgccgccgtgtatcgccccgccctgggcggcaaggctggcccggtcggcaccagttgcgtgagcggaaagatggccgcttcccggccctgctgcagggagctcaaaatggaggacgcggcgctcgggagagcgggcgggtgagtcacccacacaaaggaaaagggcctttccgtcctcagccgtcgcttcatgtgactccacggagtaccgggcgccgtccaggcacctcgattagttctcgagcttttggagtacgtcgtctttaggttggggggaggggttttatgcgatggagtttccccacactgagtgggtggagactgaagttaggccagcttggcacttgatgtaattctccttggaatttgccctttttgagtttggatcttggttcattctcaagcctcagacagtggttcaaagtttttttcttccatttcaggtgtcgtga

SEQ ID NO: 988 - DNA, 227 bp, synthetic construct
  source 1..227: mol_type = other DNA
gcccgtcagtgggcagagcgcacatcgcccacagtccccgagaagttggggggaggggtcggcaattgaaccggtgcctagagaaggtggcgcggggtaaactgggaaagtgatgtcgtgtactggctccgcctttttcccgagggtgggggagaaccgtatataagtgcagtagtcgccgtgaacgttctttttcgcaacgggtttgccgccagaacacgcgtaag

SEQ ID NO: 989 - skipped

SEQ ID NO: 990 - DNA, 16 bp, synthetic construct
  source 1..16: mol_type = other DNA
ggtggagaagagcatg

SEQ ID NO: 991 - DNA, 27 bp, synthetic construct
  source 1..27: mol_type = other DNA
gtcatcactgaggtggagaagagcatg

SEQ ID NO: 992-994 - skipped (3 entries)

SEQ ID NO: 995 - DNA, 222 bp, synthetic construct
  source 1..222: mol_type = other DNA
gcccgtcagtgggcagagcgcacatcgcccacagtccccgagaagttggggggaggggtcggcaattgaaccggtgcctagagaaggtggcgcggggtaaactgggaaagtgatgtcgtgtactggctccgcctttttcccgagggtgggggagaaccgtatataagtgcagtagtcgccgtgaacgttctttttcgcaacgggtttgccgccagaacacag

SEQ ID NO: 996 - DNA, 222 bp, synthetic construct
  source 1..222: mol_type = other DNA
gcccgtcagtgggcagagcgcacatcgcccacagtccccgagaagttggggggaggggtcggcaattgaaccggtgcctagagaaggtggcgcggggtaaactgggaaagtgatgtcgtgtactggctccgcctttttcccgagggtgggggagaaccgtatataagtgcagtagtcgccgtgaacgttctttttcgcaacgggtttgccgccagaacacgc

SEQ ID NO: 997 - skipped

SEQ ID NO: 998 - DNA, 229 bp, synthetic construct
  source 1..229: mol_type = other DNA
gtgcccgtcagtgggcagagcgcacatcgcccacagtccccgagaagttggggggaggggtcggcaattgaaccggtgcctagagaaggtggcgcggggtaaactgggaaagtgatgtcgtgtactggctccgcctttttcccgagggtgggggagaaccgtatataagtgcagtagtcgccgtgaacgttctttttcgcaacgggtttgccgccagaacacgcgtaag

SEQ ID NO: 999 - DNA, 235 bp, synthetic construct
  source 1..235: mol_type = other DNA
gctccggtgcccgtcagtgggcagagcgcacatcgcccacagtccccgagaagttggggggaggggtcggcaattgaaccggtgcctagagaaggtggcgcggggtaaactgggaaagtgatgtcgtgtactggctccgcctttttcccgagggtgggggagaaccgtatataagtgcagtagtcgccgtgaacgttctttttcgcaacgggtttgccgccagaacacgcgtaag

SEQ ID NO: 1000 - DNA, 241 bp, synthetic construct
  source 1..241: mol_type = other DNA
cgtgaggctccggtgcccgtcagtgggcagagcgcacatcgcccacagtccccgagaagttggggggaggggtcggcaattgaaccggtgcctagagaaggtggcgcggggtaaactgggaaagtgatgtcgtgtactggctccgcctttttcccgagggtgggggagaaccgtatataagtgcagtagtcgccgtgaacgttctttttcgcaacgggtttgccgccagaacacgcgtaag

SEQ ID NO: 1001 - DNA, 236 bp, synthetic construct
  source 1..236: mol_type = other DNA
cgtgaggctccggtgcccgtcagtgggcagagcgcacatcgcccacagtccccgagaagttggggggaggggtcggcaattgaaccggtgcctagagaaggtggcgcggggtaaactgggaaagtgatgtcgtgtactggctccgcctttttcccgagggtgggggagaaccgtatataagtgcagtagtcgccgtgaacgttctttttcgcaacgggtttgccgccagaacacag

SEQ ID NO: 1002 - DNA, 246 bp, synthetic construct
  source 1..246: mol_type = other DNA
gcatgcgtgaggctccggtgcccgtcagtgggcagagcgcacatcgcccacagtccccgagaagttggggggaggggtcggcaattgaaccggtgcctagagaaggtggcgcggggtaaactgggaaagtgatgtcgtgtactggctccgcctttttcccgagggtgggggagaaccgtatataagtgcagtagtcgccgtgaacgttctttttcgcaacgggtttgccgccagaacacgcgtaag

SEQ ID NO: 1003 - DNA, 241 bp, synthetic construct
  source 1..241: mol_type = other DNA
gcatgcgtgaggctccggtgcccgtcagtgggcagagcgcacatcgcccacagtccccgagaagttggggggaggggtcggcaattgaaccggtgcctagagaaggtggcgcggggtaaactgggaaagtgatgtcgtgtactggctccgcctttttcccgagggtgggggagaaccgtatataagtgcagtagtcgccgtgaacgttctttttcgcaacgggtttgccgccagaacacag

SEQ ID NO: 1004 - DNA, 257 bp, synthetic construct
  source 1..257: mol_type = other DNA
ggtggagaagagcatgcgtgaggctccggtgcccgtcagtgggcagagcgcacatcgcccacagtccccgagaagttggggggaggggtcggcaattgaaccggtgcctagagaaggtggcgcggggtaaactgggaaagtgatgtcgtgtactggctccgcctttttcccgagggtgggggagaaccgtatataagtgcagtagtcgccgtgaacgttctttttcgcaacgggtttgccgccagaacacgcgtaag

SEQ ID NO: 1005 - DNA, 252 bp, synthetic construct
  source 1..252: mol_type = other DNA
ggtggagaagagcatgcgtgaggctccggtgcccgtcagtgggcagagcgcacatcgcccacagtccccgagaagttggggggaggggtcggcaattgaaccggtgcctagagaaggtggcgcggggtaaactgggaaagtgatgtcgtgtactggctccgcctttttcccgagggtgggggagaaccgtatataagtgcagtagtcgccgtgaacgttctttttcgcaacgggtttgccgccagaacacag

SEQ ID NO: 1006 - DNA, 268 bp, synthetic construct
  source 1..268: mol_type = other DNA
gtcatcactgaggtggagaagagcatgcgtgaggctccggtgcccgtcagtgggcagagcgcacatcgcccacagtccccgagaagttggggggaggggtcggcaattgaaccggtgcctagagaaggtggcgcggggtaaactgggaaagtgatgtcgtgtactggctccgcctttttcccgagggtgggggagaaccgtatataagtgcagtagtcgccgtgaacgttctttttcgcaacgggtttgccgccagaacacgcgtaag

SEQ ID NO: 1007 - DNA, 263 bp, synthetic construct
  source 1..263: mol_type = other DNA
gtcatcactgaggtggagaagagcatgcgtgaggctccggtgcccgtcagtgggcagagcgcacatcgcccacagtccccgagaagttggggggaggggtcggcaattgaaccggtgcctagagaaggtggcgcggggtaaactgggaaagtgatgtcgtgtactggctccgcctttttcccgagggtgggggagaaccgtatataagtgcagtagtcgccgtgaacgttctttttcgcaacgggtttgccgccagaacacag

SEQ ID NO: 1008-1099 - skipped (92 entries)

SEQ ID NO: 1100 - protein, 6 aa, synthetic construct
SPHRGP

SEQ ID NO: 1101 - protein, 6 aa, synthetic construct
SPHRGG

SEQ ID NO: 1102 - protein, 6 aa, synthetic construct
SPHHGR

SEQ ID NO: 1103 - protein, 6 aa, synthetic construct
SPHGRS

SEQ ID NO: 1104 - protein, 6 aa, synthetic construct
SPHAMR

SEQ ID NO: 1105 - protein, 6 aa, synthetic construct
SPHAQR

SEQ ID NO: 1106 - protein, 6 aa, synthetic construct
SPHRAT

SEQ ID NO: 1107 - protein, 6 aa, synthetic construct
SPHRGI

SEQ ID NO: 1108 - protein, 6 aa, synthetic construct
SPHARV

SEQ ID NO: 1109 - protein, 6 aa, synthetic construct
SPHQSR

SEQ ID NO: 1110 - protein, 6 aa, synthetic construct
SPHARG

SEQ ID NO: 1111 - protein, 6 aa, synthetic construct
SPHRGL

SEQ ID NO: 1112 - protein, 6 aa, synthetic construct
SPHRGM

SEQ ID NO: 1113 - protein, 6 aa, synthetic construct
SPHQVR

SEQ ID NO: 1114 - protein, 6 aa, synthetic construct
SPHRSL

SEQ ID NO: 1115 - protein, 6 aa, synthetic construct
SPHGRN

SEQ ID NO: 1116 - protein, 6 aa, synthetic construct
SPHVRQ

SEQ ID NO: 1117 - protein, 6 aa, synthetic construct
SPHQRS

SEQ ID NO: 1118 - protein, 6 aa, synthetic construct
SPHGFR

SEQ ID NO: 1119 - protein, 6 aa, synthetic construct
SPHRTA

SEQ ID NO: 1120 - protein, 6 aa, synthetic construct
SPHGKW

SEQ ID NO: 1121 - protein, 6 aa, synthetic construct
SPHSRL

SEQ ID NO: 1122 - protein, 6 aa, synthetic construct
SPHTRP

SEQ ID NO: 1123 - protein, 6 aa, synthetic construct
SPHGRG

SEQ ID NO: 1124 - protein, 6 aa, synthetic construct
SPHSRM

SEQ ID NO: 1125 - protein, 6 aa, synthetic construct
SPHRAA

SEQ ID NO: 1126 - protein, 6 aa, synthetic construct
SPHGGK

SEQ ID NO: 1127 - protein, 6 aa, synthetic construct
SPHGRL

SEQ ID NO: 1128 - protein, 6 aa, synthetic construct
SPHSRP

SEQ ID NO: 1129 - protein, 6 aa, synthetic construct
SPHANR

SEQ ID NO: 1130 - protein, 6 aa, synthetic construct
SPHAVR

SEQ ID NO: 1131 - protein, 6 aa, synthetic construct
SPHRYT

SEQ ID NO: 1132 - protein, 6 aa, synthetic construct
SPHRSF

SEQ ID NO: 1133 - protein, 6 aa, synthetic construct
SPHRAG

SEQ ID NO: 1134 - protein, 6 aa, synthetic construct
SPHRAQ

SEQ ID NO: 1135 - protein, 6 aa, synthetic construct
SPHSPR

SEQ ID NO: 1136 - protein, 6 aa, synthetic construct
SPHRAP

SEQ ID NO: 1137 - protein, 6 aa, synthetic construct
SPHPSR

SEQ ID NO: 1138 - protein, 6 aa, synthetic construct
SPHRGS

SEQ ID NO: 1139 - protein, 6 aa, synthetic construct
SPHRMV

SEQ ID NO: 1140 - protein, 6 aa, synthetic construct
SPHARL

SEQ ID NO: 1141 - protein, 6 aa, synthetic construct
SPHRTS

SEQ ID NO: 1142 - protein, 6 aa, synthetic construct
SPHHKP

SEQ ID NO: 1143 - protein, 6 aa, synthetic construct
SPHGKF

SEQ ID NO: 1144 - protein, 6 aa, synthetic construct
SPHARP

SEQ ID NO: 1145 - protein, 6 aa, synthetic construct
SPHARQ

SEQ ID NO: 1146 - protein, 6 aa, synthetic construct
SPHSGR

SEQ ID NO: 1147 - protein, 6 aa, synthetic construct
SPHTYR

SEQ ID NO: 1148 - protein, 6 aa, synthetic construct
SPHHAR

SEQ ID NO: 1149 - protein, 6 aa, synthetic construct
SPHRVS

SEQ ID NO: 1150 - protein, 6 aa, synthetic construct
SPHGNR

SEQ ID NO: 1151 - protein, 6 aa, synthetic construct
SPHSRQ

SEQ ID NO: 1152 - protein, 6 aa, synthetic construct
SPHGRV

SEQ ID NO: 1153 - protein, 6 aa, synthetic construct
SPHSIR

SEQ ID NO: 1154 - protein, 6 aa, synthetic construct
SPHRHT

SEQ ID NO: 1155 - protein, 6 aa, synthetic construct
SPHPRP

SEQ ID NO: 1156 - protein, 6 aa, synthetic construct
SPHRPM

SEQ ID NO: 1157 - protein, 6 aa, synthetic construct
SPHRQP

SEQ ID NO: 1158 - protein, 6 aa, synthetic construct
SPHSRH

SEQ ID NO: 1159 - protein, 6 aa, synthetic construct
SPHGPR

SEQ ID NO: 1160 - protein, 6 aa, synthetic construct
SPHRLL

SEQ ID NO: 1161 - protein, 6 aa, synthetic construct
SPHMHR

SEQ ID NO: 1162 - protein, 6 aa, synthetic construct
SPHKVR

SEQ ID NO: 1163 - protein, 6 aa, synthetic construct
SPHRAV

SEQ ID NO: 1164 - protein, 6 aa, synthetic construct
SPHTRT

SEQ ID NO: 1165 - protein, 6 aa, synthetic construct
SPHGYR

SEQ ID NO: 1166 - protein, 6 aa, synthetic construct
SPHAKS

SEQ ID NO: 1167 - protein, 6 aa, synthetic construct
SPHQTK

SEQ ID NO: 1168 - protein, 6 aa, synthetic construct
SPHATR

SEQ ID NO: 1169 - protein, 6 aa, synthetic construct
SPHRTV

SEQ ID NO: 1170 - protein, 6 aa, synthetic construct
SPHVSR

SEQ ID NO: 1171 - protein, 6 aa, synthetic construct
SPHGLR

SEQ ID NO: 1172 - protein, 6 aa, synthetic construct
SPHALR

SEQ ID NO: 1173 - protein, 6 aa, synthetic construct
SPHRVT

SEQ ID NO: 1174 - protein, 6 aa, synthetic construct
SPHQRN

SEQ ID NO: 1175 - protein, 6 aa, synthetic construct
SPHNNR

SEQ ID NO: 1176 - protein, 6 aa, synthetic construct
SPHPGR

SEQ ID NO: 1177 - protein, 6 aa, synthetic construct
SPHRPV

SEQ ID NO: 1178 - protein, 6 aa, synthetic construct
SPHART

SEQ ID NO: 1179 - protein, 6 aa, synthetic construct
SPHMRA

SEQ ID NO: 1180 - protein, 6 aa, synthetic construct
SPHRTP

SEQ ID NO: 1181 - protein, 6 aa, synthetic construct
SPHYRT

SEQ ID NO: 1182 - protein, 6 aa, synthetic construct
SPHRLG

SEQ ID NO: 1183 - protein, 6 aa, synthetic construct
SPHVRV

SEQ ID NO: 1184 - protein, 6 aa, synthetic construct
SPHRLM

SEQ ID NO: 1185 - protein, 6 aa, synthetic construct
SPHRNI

SEQ ID NO: 1186 - protein, 6 aa, synthetic construct
SPHMKG

SEQ ID NO: 1187 - protein, 6 aa, synthetic construct
SPHRPG

SEQ ID NO: 1188 - protein, 6 aa, synthetic construct
SPHSSK

SEQ ID NO: 1189 - protein, 6 aa, synthetic construct
SPHTAR

SEQ ID NO: 1190 - protein, 6 aa, synthetic construct
SPHSRS

SEQ ID NO: 1191 - protein, 6 aa, synthetic construct
SPHVKL

SEQ ID NO: 1192 - protein, 6 aa, synthetic construct
SPHMSR

SEQ ID NO: 1193 - protein, 6 aa, synthetic construct
SPHKSH

SEQ ID NO: 1194 - protein, 6 aa, synthetic construct
SPHTMR

SEQ ID NO: 1195 - protein, 6 aa, synthetic construct
SPHRPI

SEQ ID NO: 1196 - protein, 6 aa, synthetic construct
SPHVRA

SEQ ID NO: 1197 - protein, 6 aa, synthetic construct
SPHLNR

SEQ ID NO: 1198 - protein, 6 aa, synthetic construct
SPHKLV

SEQ ID NO: 1199 - protein, 6 aa, synthetic construct
SPHLRP

SEQ ID NO: 1200 - protein, 6 aa, synthetic construct
SPHRVL

SEQ ID NO: 1201 - protein, 6 aa, synthetic construct
SPHGPK

SEQ ID NO: 1202 - protein, 6 aa, synthetic construct
SPHRVM

SEQ ID NO: 1203 - protein, 6 aa, synthetic construct
SPHRTG

SEQ ID NO: 1204 - protein, 6 aa, synthetic construct
SPHRAF

SEQ ID NO: 1205 - protein, 6 aa, synthetic construct
SPHRSM

SEQ ID NO: 1206 - protein, 6 aa, synthetic construct
SPHRSV

SEQ ID NO: 1207 - protein, 6 aa, synthetic construct
SPHQQR

SEQ ID NO: 1208 - protein, 6 aa, synthetic construct
SPHIRV

SEQ ID NO: 1209 - protein, 6 aa, synthetic construct
SPHLSR

SEQ ID NO: 1210 - protein, 6 aa, synthetic construct
SPHSRF

SEQ ID NO: 1211 - protein, 6 aa, synthetic construct
SPHRSS

SEQ ID NO: 1212 - protein, 6 aa, synthetic construct
SPHAIR

SEQ ID NO: 1213 - protein, 6 aa, synthetic construct
SPHNSR

SEQ ID NO: 1214 - protein, 6 aa, synthetic construct
SPHIRP

SEQ ID NO: 1215 - protein, 6 aa, synthetic construct
SPHSRV

SEQ ID NO: 1216 - protein, 6 aa, synthetic construct
SPHRPH

SEQ ID NO: 1217 - protein, 6 aa, synthetic construct
SPHRPS

SEQ ID NO: 1218 - protein, 6 aa, synthetic construct
SPHKPW

SEQ ID NO: 1219 - protein, 6 aa, synthetic construct
SPHHKL

SEQ ID NO: 1220 - protein, 6 aa, synthetic construct
SPHGTR

SEQ ID NO: 1221 - protein, 6 aa, synthetic construct
SPHGHR

SEQ ID NO: 1222 - protein, 6 aa, synthetic construct
SPHRAS

SEQ ID NO: 1223 - protein, 6 aa, synthetic construct
SPHKNL

SEQ ID NO: 1224 - protein, 6 aa, synthetic construct
SPHRVP

SEQ ID NO: 1225 - protein, 6 aa, synthetic construct
SPHVRL

SEQ ID NO: 1226 - protein, 6 aa, synthetic construct
SPHGAK

SEQ ID NO: 1227 - protein, 6 aa, synthetic construct
SPHRST

SEQ ID NO: 1228 - protein, 6 aa, synthetic construct
SPHSRT

SEQ ID NO: 1229 - protein, 6 aa, synthetic construct
SPHGSW

SEQ ID NO: 1230 - protein, 6 aa, synthetic construct
SPHRLH

SEQ ID NO: 1231 - protein, 6 aa, synthetic construct
SPHKRS

SEQ ID NO: 1232 - protein, 6 aa, synthetic construct
SPHLRI

SEQ ID NO: 1233 - protein, 6 aa, synthetic construct
SPHYKM

SEQ ID NO: 1234 - protein, 6 aa, synthetic construct
SPHMRV

SEQ ID NO: 1235 - protein, 6 aa, synthetic construct
SPHHSY

SEQ ID NO: 1236 - protein, 6 aa, synthetic construct
SPHKYR

SEQ ID NO: 1237 - protein, 6 aa, synthetic construct
SPHKFK

SEQ ID NO: 1238 - protein, 6 aa, synthetic construct
SPHLKT

SEQ ID NO: 1239 - protein, 6 aa, synthetic construct
SPHVKN

SEQ ID NO: 1240 - protein, 6 aa, synthetic construct
SPHLRA

SEQ ID NO: 1241 - protein, 6 aa, synthetic construct
SPHHRA

SEQ ID NO: 1242 - protein, 6 aa, synthetic construct
SPHYGR

SEQ ID NO: 1243 - protein, 6 aa, synthetic construct
SPHVGR

SEQ ID NO: 1244 - protein, 6 aa, synthetic construct
SPHVRP

SEQ ID NO: 1245 - protein, 6 aa, synthetic construct
SPHVRT

SEQ ID NO: 1246 - protein, 6 aa, synthetic construct
SPHQRM

SEQ ID NO: 1247 - protein, 6 aa, synthetic construct
SPHLGR

SEQ ID NO: 1248 - protein, 6 aa, synthetic construct
SPHKRM

SEQ ID NO: 1249 - protein, 6 aa, synthetic construct
SPHMVR

SEQ ID NO: 1250 - protein, 6 aa, synthetic construct
SPHGPF

SEQ ID NO: 1251 - protein, 6 aa, synthetic construct
SPHMRN

SEQ ID NO: 1252 - protein, 6 aa, synthetic construct
SPHVRS

SEQ ID NO: 1253 - protein, 6 aa, synthetic construct
SPHKRT

SEQ ID NO: 1254 - protein, 6 aa, synthetic construct
SPHPGK

SEQ ID NO: 1255 - protein, 6 aa, synthetic construct
SPHTGR

SEQ ID NO: 1256 - protein, 6 aa, synthetic construct
SPHVQR

SEQ ID NO: 1257 - protein, 6 aa, synthetic construct
SPHNAR

SEQ ID NO: 1258 - protein, 6 aa, synthetic construct
SPHWPK

SEQ ID NO: 1259 - protein, 6 aa, synthetic construct
SPHIAK

SEQ ID NO: 1260 - protein, 6 aa, synthetic construct
SPHAKF

SEQ ID NO: 1261 - protein, 6 aa, synthetic construct
SPHARA

SEQ ID NO: 1262 - protein, 6 aa, synthetic construct
SPHMRF

SEQ ID NO: 1263 - protein, 6 aa, synthetic construct
SPHTRF

SEQ ID NO: 1264 - protein, 6 aa, synthetic construct
SPHSRI

SEQ ID NO: 1265 - protein, 6 aa, synthetic construct
SPHPIR

SEQ ID NO: 1266 - protein, 6 aa, synthetic construct
SPHHMR

SEQ ID NO: 1267 - protein, 6 aa, synthetic construct
SPHMQR

SEQ ID NO: 1268 - protein, 6 aa, synthetic construct
SPHSAY

SEQ ID NO: 1269 - protein, 6 aa, synthetic construct
SPHVSK

SEQ ID NO: 1270 - protein, 6 aa, synthetic construct
SPHMRS

SEQ ID NO: 1271 - protein, 6 aa, synthetic construct
SPHERF

SEQ ID NO: 1272 - protein, 6 aa, synthetic construct
SPHLRG

SEQ ID NO: 1273 - protein, 6 aa, synthetic construct
SPHHYA

SEQ ID NO: 1274 - protein, 6 aa, synthetic construct
SPHAGP

SEQ ID NO: 1275 - protein, 6 aa, synthetic construct
SPHPKA

SEQ ID NO: 1276 - protein, 6 aa, synthetic construct
SPHAHL

SEQ ID NO: 1277 - protein, 6 aa, synthetic construct
SPHEKW

SEQ ID NO: 1278 - protein, 6 aa, synthetic construct
SPHMPR

SEQ ID NO: 1279 - protein, 6 aa, synthetic construct
SPHLVR

SEQ ID NO: 1280 - protein, 6 aa, synthetic construct
SPHPRT

SEQ ID NO: 1281 - protein, 6 aa, synthetic construct
SPHGPA

SEQ ID NO: 1282 - protein, 6 aa, synthetic construct
SPHLPR

SEQ ID NO: 1283 - protein, 6 aa, synthetic construct
SPHDRG

SEQ ID NO: 1284 - protein, 6 aa, synthetic construct
NSPHRS

SEQ ID NO: 1285 - protein, 6 aa, synthetic construct
TSPHRG

SEQ ID NO: 1286 - protein, 6 aa, synthetic construct
GSPHKR

SEQ ID NO: 1287 - protein, 6 aa, synthetic construct
NSPHKQ

SEQ ID NO: 1288 - protein, 6 aa, synthetic construct
GSPHRH

SEQ ID NO: 1289 - protein, 6 aa, synthetic construct
GSPHRS

SEQ ID NO: 1290 - protein, 6 aa, synthetic construct
NSPHKW

SEQ ID NO: 1291 - protein, 6 aa, synthetic construct
SSPHSR

SEQ ID NO: 1292 - protein, 6 aa, synthetic construct
NSPHSR

SEQ ID NO: 1293 - protein, 6 aa, synthetic construct
GSPHIK

SEQ ID NO: 1294 - protein, 6 aa, synthetic construct
QSPHRS

SEQ ID NO: 1295 - protein, 6 aa, synthetic construct
GSPHRG

SEQ ID NO: 1296 - protein, 6 aa, synthetic construct
SSPHKV

SEQ ID NO: 1297 - protein, 6 aa, synthetic construct
GSPHSR

SEQ ID NO: 1298 - protein, 6 aa, synthetic construct
SSPHRG

SEQ ID NO: 1299 - protein, 6 aa, synthetic construct
GSPHMK

SEQ ID NO: 1300 - protein, 6 aa, synthetic construct
GSPHGR

SEQ ID NO: 1301 - protein, 6 aa, synthetic construct
QSPHSR

SEQ ID NO: 1302 - protein, 6 aa, synthetic construct
ASPHRS

SEQ ID NO: 1303 - protein, 6 aa, synthetic construct
SSPHRI

SEQ ID NO: 1304 - protein, 6 aa, synthetic construct
SSPHVK

SEQ ID NO: 1305 - protein, 6 aa, synthetic construct
GSPHRL

SEQ ID NO: 1306 - protein, 6 aa, synthetic construct
TSPHHR

SEQ ID NO: 1307 - protein, 6 aa, synthetic construct
SSPHNR

SEQ ID NO: 1308 - protein, 6 aa, synthetic construct
ASPHRG

SEQ ID NO: 1309 - protein, 6 aa, synthetic construct
ASPHGR

SEQ ID NO: 1310 - protein, 6 aa, synthetic construct
GSPHIR

SEQ ID NO: 1311 - protein, 6 aa, synthetic construct
MSPHSR

SEQ ID NO: 1312 - protein, 6 aa, synthetic construct
HSPHRN

SEQ ID NO: 1313 - protein, 6 aa, synthetic construct
TSPHKK

SEQ ID NO: 1314 - protein, 6 aa, synthetic construct
NSPHRT

SEQ ID NO: 1315 - protein, 6 aa, synthetic construct
GSPHRI

SEQ ID NO: 1316 - protein, 6 aa, synthetic construct
SSPHRA

SEQ ID NO: 1317 - protein, 6 aa, synthetic construct
ASPHQR

SEQ ID NO: 1318 - protein, 6 aa, synthetic construct
GSPHAH

SEQ ID NO: 1319 - protein, 6 aa, synthetic construct
ESPHRK

SEQ ID NO: 1320 - protein, 6 aa, synthetic construct
VSPHRS

SEQ ID NO: 1321 - protein, 6 aa, synthetic construct
GSPHRN

SEQ ID NO: 1322 - protein, 6 aa, synthetic construct
YSPHRS

SEQ ID NO: 1323 - protein, 6 aa, synthetic construct
ASPHKI

SEQ ID NO: 1324 - protein, 6 aa, synthetic construct
SSPHFR

SEQ ID NO: 1325 - protein, 6 aa, synthetic construct
QSPHNR

SEQ ID NO: 1326 - protein, 6 aa, synthetic construct
VSPHRG

SEQ ID NO: 1327 - protein, 6 aa, synthetic construct
MSPHRG

SEQ ID NO: 1328 - protein, 6 aa, synthetic construct
SSPHMR

SEQ ID NO: 1329 - protein, 6 aa, synthetic construct
ASPHAK

SEQ ID NO: 1330 - protein, 6 aa, synthetic construct
LSPHSR

SEQ ID NO: 1331 - protein, 6 aa, synthetic construct
HSPHRS

SEQ ID NO: 1332 - protein, 6 aa, synthetic construct
QSPHKG

SEQ ID NO: 1333 - protein, 6 aa, synthetic construct
QSPHRA

SEQ ID NO: 1334 - protein, 6 aa, synthetic construct
ASPHRV

SEQ ID NO: 1335 - protein, 6 aa, synthetic construct
VSPHRL

SEQ ID NO: 1336 - protein, 6 aa, synthetic construct
ASPHNR

SEQ ID NO: 1337 - protein, 6 aa, synthetic construct
ASPHRA

SEQ ID NO: 1338 - protein, 6 aa, synthetic construct
SSPHVR

SEQ ID NO: 1339 - protein, 6 aa, synthetic construct
TSPHRM

SEQ ID NO: 1340 - protein, 6 aa, synthetic construct
GSPHVK

SEQ ID NO: 1341 - protein, 6 aa, synthetic construct
SSPHGR

SEQ ID NO: 1342 - protein, 6 aa, synthetic construct
VSPHGR

SEQ ID NO: 1343 - protein, 6 aa, synthetic construct
SSPHRV

SEQ ID NO: 1344 - protein, 6 aa, synthetic construct
TSPHFK

SEQ ID NO: 1345 - protein, 6 aa, synthetic construct
QSPHRM

SEQ ID NO: 1346 - protein, 6 aa, synthetic construct
HSPHQR

SEQ ID NO: 1347 - protein, 6 aa, synthetic construct
TSPHNR

SEQ ID NO: 1348 - protein, 6 aa, synthetic construct
ASPHVR

SEQ ID NO: 1349 - protein, 6 aa, synthetic construct
ASPHGK

SEQ ID NO: 1350 - protein, 6 aa, synthetic construct
GSPHPR

SEQ ID NO: 1351 - protein, 6 aa, synthetic construct
SSPHLR

SEQ ID NO: 1352 - protein, 6 aa, synthetic construct
LSPHKM

SEQ ID NO: 1353 - protein, 6 aa, synthetic construct
NSPHRL

SEQ ID NO: 1354 - protein, 6 aa, synthetic construct
ESPHQR

SEQ ID NO: 1355 - protein, 6 aa, synthetic construct
MSPHGR

SEQ ID NO: 1356 - protein, 6 aa, synthetic construct
GSPHLR

SEQ ID NO: 1357 - protein, 6 aa, synthetic construct
QSPHRV

SEQ ID NO: 1358 - protein, 6 aa, synthetic construct
TSPHRQ

SEQ ID NO: 1359 - protein, 6 aa, synthetic construct
VSPHSR

SEQ ID NO: 1360 - protein, 6 aa, synthetic construct
TSPHKN

SEQ ID NO: 1361 - protein, 6 aa, synthetic construct
PSPHDR

SEQ ID NO: 1362 - protein, 6 aa, synthetic construct
SSPHGF

SEQ ID NO: 1363 - protein, 6 aa, synthetic construct
FSPHKS

SEQ ID NO: 1364 - protein, 6 aa, synthetic construct
LSPHVR

SEQ ID NO: 1365 - protein, 6 aa, synthetic construct
HSPHRV

SEQ ID NO: 1366 - protein, 6 aa, synthetic construct
SSPHRP

SEQ ID NO: 1367 - protein, 6 aa, synthetic construct
MSPHTR

SEQ ID NO: 1368 - protein, 6 aa, synthetic construct
TSPHFR

SEQ ID NO: 1369 - protein, 6 aa, synthetic construct
RSPHPT

SEQ ID NO: 1370 - protein, 6 aa, synthetic construct
LSPHHR

SEQ ID NO: 1371 - protein, 6 aa, synthetic construct
NSPHRP

SEQ ID NO: 1372 - protein, 6 aa, synthetic construct
RSPHSQ

SEQ ID NO: 1373 - protein, 6 aa, synthetic construct
LSPHRQ

SEQ ID NO: 1374 - protein, 6 aa, synthetic construct
PSPHRG

SEQ ID NO: 1375 - protein, 6 aa, synthetic construct
RSPHGM

SEQ ID NO: 1376 - protein, 6 aa, synthetic construct
ASPHLR

SEQ ID NO: 1377 - protein, 6 aa, synthetic construct
SESPHR

SEQ ID NO: 1378 - protein, 6 aa, synthetic construct
RQSPHT

SEQ ID NO: 1379 - protein, 6 aa, synthetic construct
SASPHR

SEQ ID NO: 1380 - protein, 6 aa, synthetic construct
SRSPHS

SEQ ID NO: 1381 - protein, 6 aa, synthetic construct
RVSPHA

SEQ ID NO: 1382 - protein, 6 aa, synthetic construct
QRSPHA

SEQ ID NO: 1383 - protein, 6 aa, synthetic construct
TMSPHR

SEQ ID NO: 1384 - protein, 6 aa, synthetic construct
RQSPHG

SEQ ID NO: 1385 - protein, 6 aa, synthetic construct
RSSPHN

SEQ ID NO: 1386 - protein, 6 aa, synthetic construct
ASSPHR

SEQ ID NO: 1387 - protein, 6 aa, synthetic construct
SLSPHR

SEQ ID NO: 1388 - protein, 6 aa, synthetic construct
NVSPHR

SEQ ID NO: 1389 - protein, 6 aa, synthetic construct
RVSPHS

SEQ ID NO: 1390 - protein, 6 aa, synthetic construct
RTSPHT

SEQ ID NO: 1391 - protein, 6 aa, synthetic construct
SVSPHR

SEQ ID NO: 1392 - protein, 6 aa, synthetic construct
EASPHK

SEQ ID NO: 1393 - protein, 6 aa, synthetic construct
HLSPHK

SEQ ID NO: 1394 - protein, 6 aa, synthetic construct
DRSPHN

SEQ ID NO: 1395 - protein, 6 aa, synthetic construct
PSSPHR

SEQ ID NO: 1396 - protein, 6 aa, synthetic construct
ANSPHR

SEQ ID NO: 1397 - protein, 6 aa, synthetic construct
ARSPHS

SEQ ID NO: 1398 - protein, 6 aa, synthetic construct
RTSPHA

SEQ ID NO: 1399 - protein, 6 aa, synthetic construct
RVSPHT

SEQ ID NO: 1400 - protein, 6 aa, synthetic construct
RASPHS

SEQ ID NO: 1401 - protein, 6 aa, synthetic construct
ISSPHR

SEQ ID NO: 1402 - protein, 6 aa, synthetic construct
QRSPHN

SEQ ID NO: 1403 - protein, 6 aa, synthetic construct
TRSPHS

SEQ ID NO: 1404 - protein, 6 aa, synthetic construct
SSSPHR

SEQ ID NO: 1405 - protein, 6 aa, synthetic construct
HASPHR

SEQ ID NO: 1406 - protein, 6 aa, synthetic construct
HLSPHR

SEQ ID NO: 1407 - protein, 6 aa, synthetic construct
WGSPHS

SEQ ID NO: 1408 - protein, 6 aa, synthetic construct
SGSPHK

SEQ ID NO: 1409 - protein, 6 aa, synthetic construct
LSSPHR

SEQ ID NO: 1410 - protein, 6 aa, synthetic construct
GGSPHR

SEQ ID NO: 1411 - protein, 6 aa, synthetic construct
RTSPHW

SEQ ID NO: 1412 - protein, 6 aa, synthetic construct
WQSPHN

SEQ ID NO: 1413 - protein, 6 aa, synthetic construct
QKSPHA

SEQ ID NO: 1414 - protein, 6 aa, synthetic construct
SHSPHR

SEQ ID NO: 1415 - protein, 6 aa, synthetic construct
HMSPHR

SEQ ID NO: 1416 - protein, 6 aa, synthetic construct
RYSPHG

SEQ ID NO: 1417 - protein, 6 aa, synthetic construct
RVSPHG

SEQ ID NO: 1418 - protein, 6 aa, synthetic construct
LPSPHR

SEQ ID NO: 1419 - protein, 6 aa, synthetic construct
RVSPHV

SEQ ID NO: 1420 - protein, 6 aa, synthetic construct
SFSPHR

SEQ ID NO: 1421 - protein, 6 aa, synthetic construct
RSSPHM

SEQ ID NO: 1422 - protein, 6 aa, synthetic construct
LLSPHR

SEQ ID NO: 1423 - protein, 6 aa, synthetic construct
RSSPHA

SEQ ID NO: 1424 - protein, 6 aa, synthetic construct
AVSPHR

SEQ ID NO: 1425 - protein, 6 aa, synthetic construct
RNSPHL

SEQ ID NO: 1426 - protein, 6 aa, synthetic construct
RLSPHV

SEQ ID NO: 1427 - protein, 6 aa, synthetic construct
RYSPHT

SEQ ID NO: 1428 - protein, 6 aa, synthetic construct
SRSPHG

SEQ ID NO: 1429 - protein, 6 aa, synthetic construct
GRSPHG

SEQ ID NO: 1430 - protein, 6 aa, synthetic construct
MRSPHS

SEQ ID NO: 1431 - protein, 6 aa, synthetic construct
LASPHR

SEQ ID NO: 1432 - protein, 6 aa, synthetic construct
YRSPHS

SEQ ID NO: 1433 - protein, 6 aa, synthetic construct
KESPHR

SEQ ID NO: 1434 - protein, 6 aa, synthetic construct
RTSPHL

SEQ ID NO: 1435 - protein, 6 aa, synthetic construct
SVSPHG

SEQ ID NO: 1436 - protein, 6 aa, synthetic construct
MGSPHR

SEQ ID NO: 1437 - protein, 6 aa, synthetic construct
RSSPHL

SEQ ID NO: 1438 - protein, 6 aa, synthetic construct
NSVSPH

SEQ ID NO: 1439 - protein, 6 aa, synthetic construct
LFKSPH

SEQ ID NO: 1440 - protein, 6 aa, synthetic construct
STSPHR

SEQ ID NO: 1441 - protein, 6 aa, synthetic construct
QQSPHR

SEQ ID NO: 1442 - protein, 6 aa, synthetic construct
QSSPHR

SEQ ID NO: 1443 - protein, 6 aa, synthetic construct
QASPHR

SEQ ID NO: 1444 - protein, 6 aa, synthetic construct
MSSPHR

SEQ ID NO: 1445 - protein, 6 aa, synthetic construct
RSSPHP

SEQ ID NO: 1446 - protein, 6 aa, synthetic construct
SQSPHR

SEQ ID NO: 1447 - protein, 6 aa, synthetic construct
DSSPHR

SEQ ID NO: 1448 - protein, 6 aa, synthetic construct
NKSPHK

SEQ ID NO: 1449 - protein, 6 aa, synthetic construct
NGSPHR

SEQ ID NO: 1450 - protein, 6 aa, synthetic construct
NSSPHR

SEQ ID NO: 1451 - protein, 6 aa, synthetic construct
YGSPHR

SEQ ID NO: 1452 - protein, 6 aa, synthetic construct
PGSPHR

SEQ ID NO: 1453 - protein, 6 aa, synthetic construct
RGSPHK

SEQ ID NO: 1454 - protein, 6 aa, synthetic construct
NRSPHK

SEQ ID NO: 1455 - protein, 6 aa, synthetic construct
HTSPHR

SEQ ID NO: 1456 - protein, 6 aa, synthetic construct
PTSPHR

SEQ ID NO: 1457 - protein, 6 aa, synthetic construct
TGSPHR

SEQ ID NO: 1458 - protein, 6 aa, synthetic construct
GSSPHR

SEQ ID NO: 1459 - protein, 6 aa, synthetic construct
LGSPHR

SEQ ID NO: 1460 - protein, 6 aa, synthetic construct
KGSPHK

SEQ ID NO: 1461 - protein, 6 aa, synthetic construct
LNSPHK

SEQ ID NO: 1462 - protein, 6 aa, synthetic construct
RSSPHY

SEQ ID NO: 1463 - protein, 6 aa, synthetic construct
RESPHR

SEQ ID NO: 1464 - protein, 6 aa, synthetic construct
HSSPHR

SEQ ID NO: 1465 - protein, 6 aa, synthetic construct
MTSPHR

SEQ ID NO: 1466 - protein, 6 aa, synthetic construct
SWSPHR

SEQ ID NO: 1467 - protein, 6 aa, synthetic construct
QTSPHR

SEQ ID NO: 1468 - protein, 6 aa, synthetic construct
THSPHR

SEQ ID NO: 1469 - protein, 6 aa, synthetic construct
VASPHR

SEQ ID NO: 1470 - protein, 6 aa, synthetic construct
HGSPHR

SEQ ID NO: 1471 - protein, 6 aa, synthetic construct
RMSPHG

SEQ ID NO: 1472 - protein, 6 aa, synthetic construct
ALSPHR

SEQ ID NO: 1473 - protein, 6 aa, synthetic construct
RMSPHP

SEQ ID NO: 1474 - protein, 6 aa, synthetic construct
VHSPHR

SEQ ID NO: 1475 - protein, 6 aa, synthetic construct
RQSPHK

SEQ ID NO: 1476 - protein, 6 aa, synthetic construct
RTSPHP

SEQ ID NO: 1477 - protein, 6 aa, synthetic construct
YNSPHR

SEQ ID NO: 1478 - protein, 6 aa, synthetic construct
QVSPHR

SEQ ID NO: 1479 - protein, 6 aa, synthetic construct
YRSPHK

SEQ ID NO: 1480 - protein, 6 aa, synthetic construct
RASPHP

SEQ ID NO: 1481 - protein, 6 aa, synthetic construct
PYSPHR

SEQ ID NO: 1482 - protein, 6 aa, synthetic construct
WLSPHR

SEQ ID NO: 1483 - protein, 6 aa, synthetic construct
LSSPHK

SEQ ID NO: 1484 - protein, 6 aa, synthetic construct
VSSPHR

SEQ ID NO: 1485 - protein, 6 aa, synthetic construct
RLSPHY

SEQ ID NO: 1486 - protein, 6 aa, synthetic construct
RMSPHS

SEQ ID NO: 1487 - protein, 6 aa, synthetic construct
RSSPHW

SEQ ID NO: 1488 - protein, 6 aa, synthetic construct
RHSPHK

SEQ ID NO: 1489 - protein, 6 aa, synthetic construct
IHSPHK

SEQ ID NO: 1490 - protein, 6 aa, synthetic construct
NASPHR

SEQ ID NO: 1491 - protein, 6 aa, synthetic construct
DVSPHR

SEQ ID NO: 1492 - protein, 6 aa, synthetic construct
RASPHY

SEQ ID NO: 1493 - protein, 6 aa, synthetic construct
RNSPHG

SEQ ID NO: 1494 - protein, 6 aa, synthetic construct
HVSPHK

SEQ ID NO: 1495 - protein, 6 aa, synthetic construct
ARSPHY

SEQ ID NO: 1496 - protein, 6 aa, synthetic construct
RLSPHT

SEQ ID NO: 1497 - protein, 6 aa, synthetic construct
IQSPHR

SEQ ID NO: 1498 - protein, 6 aa, synthetic construct
IRSPHK

SEQ ID NO: 1499 - protein, 6 aa, synthetic construct
ERSPHR

SEQ ID NO: 1500 - protein, 6 aa, synthetic construct
RFSPHS

SEQ ID NO: 1501 - protein, 6 aa, synthetic construct
LGSPHS

SEQ ID NO: 1502 - protein, 6 aa, synthetic construct
RLSPHG

SEQ ID NO: 1503 - protein, 6 aa, synthetic construct
RTSPHS

SEQ ID NO: 1504 - protein, 6 aa, synthetic construct
TTSPHS

SEQ ID NO: 1505 - protein, 6 aa, synthetic construct
SRSPHN

SEQ ID NO: 1506 - protein, 6 aa, synthetic construct
RGSPHL

SEQ ID NO: 1507 - protein, 6 aa, synthetic construct
WTSPHS

SEQ ID NO: 1508 - protein, 6 aa, synthetic construct
PFSPHG

SEQ ID NO: 1509 - protein, 6 aa, synthetic construct
HRSPHP

SEQ ID NO: 1510 - protein, 6 aa, synthetic construct
VYSPHS

SEQ ID NO: 1511 - protein, 6 aa, synthetic construct
RMSPHQ

SEQ ID NO: 1512 - protein, 6 aa, synthetic construct
PRSPHG

SEQ ID NO: 1513 - protein, 6 aa, synthetic construct
LRSPHS

SEQ ID NO: 1514 - protein, 6 aa, synthetic construct
LASPHK

SEQ ID NO: 1515 - protein, 6 aa, synthetic construct
WASPHR

SEQ ID NO: 1516 - protein, 6 aa, synthetic construct
RGSPHQ

SEQ ID NO: 1517 - protein, 6 aa, synthetic construct
WRSPHG

SEQ ID NO: 1518 - protein, 6 aa, synthetic construct
VRSPHS

SEQ ID NO: 1519 - protein, 6 aa, synthetic construct
PRSPHM

SEQ ID NO: 1520 - protein, 6 aa, synthetic construct
VLSPHR

SEQ ID NO: 1521 - protein, 6 aa, synthetic construct
MESPHR

SEQ ID NO: 1522 - protein, 6 aa, synthetic construct
RQSPHI

SEQ ID NO: 1523 - protein, 6 aa, synthetic construct
GTSPHA

SEQ ID NO: 1524 - protein, 6 aa, synthetic construct
SVSPHQ

SEQ ID NO: 1525 - protein, 6 aa, synthetic construct
PLSPHA

SEQ ID NO: 1526 - protein, 6 aa, synthetic construct
PRSPHA

SEQ ID NO: 1527 - protein, 6 aa, synthetic construct
PRSPHT

SEQ ID NO: 1528 - protein, 6 aa, synthetic construct
STSPHS

SEQ ID NO: 1529 - protein, 6 aa, synthetic construct
EKSPHR

SEQ ID NO: 1530 - protein, 6 aa, synthetic construct
SRSPHA

SEQ ID NO: 1531 - protein, 6 aa, synthetic construct
TLSPHS

SEQ ID NO: 1532 - protein, 6 aa, synthetic construct
RSSPHS

SEQ ID NO: 1533 - protein, 6 aa, synthetic construct
ARSPHG

SEQ ID NO: 1534 - protein, 6 aa, synthetic construct
LGSPHQ

SEQ ID NO: 1535 - protein, 6 aa, synthetic construct
MSSPHA

SEQ ID NO: 1536 - protein, 6 aa, synthetic construct
RTSPHV

SEQ ID NO: 1537 - protein, 6 aa, synthetic construct
RLSPHA

SEQ ID NO: 1538 - protein, 6 aa, synthetic construct
AKSPHW

SEQ ID NO: 1539 - protein, 6 aa, synthetic construct
QRSPHS

SEQ ID NO: 1540 - protein, 6 aa, synthetic construct
HISPHR

SEQ ID NO: 1541 - protein, 6 aa, synthetic construct
RGSPHS

SEQ ID NO: 1542 - protein, 6 aa, synthetic construct
RNSPHH

SEQ ID NO: 1543 - protein, 6 aa, synthetic construct
ALSPHS

SEQ ID NO: 1544 - protein, 6 aa, synthetic construct
QPSPHR

SEQ ID NO: 1545 - protein, 6 aa, synthetic construct
TLSPHV

SEQ ID NO: 1546 - protein, 6 aa, synthetic construct
VPSPHR

SEQ ID NO: 1547 - protein, 6 aa, synthetic construct
RASPHN

SEQ ID NO: 1548 - protein, 6 aa, synthetic construct
IESPHR

SEQ ID NO: 1549 - protein, 6 aa, synthetic construct
IRSPHP

SEQ ID NO: 1550 - protein, 6 aa, synthetic construct
LYSPHR

SEQ ID NO: 1551 - protein, 6 aa, synthetic construct
VRSPHY

SEQ ID NO: 1552 - protein, 6 aa, synthetic construct
RMSPHV

SEQ ID NO: 1553 - protein, 6 aa, synthetic construct
RVSPHP

SEQ ID NO: 1554 - protein, 6 aa, synthetic construct
RLSPHH

SEQ ID NO: 1555 - protein, 6 aa, synthetic construct
SVSPHA

SEQ ID NO: 1556 - protein, 6 aa, synthetic construct
EWSPHR

SEQ ID NO: 1557 - protein, 6 aa, synthetic construct
RISPHL

SEQ ID NO: 1558 - protein, 6 aa, synthetic construct
YRSPHQ

SEQ ID NO: 1559 - protein, 6 aa, synthetic construct
TRSPHG

SEQ ID NO: 1560 - protein, 6 aa, synthetic construct
RLSPHL

SEQ ID NO: 1561 - protein, 6 aa, synthetic construct
GASPHS

SEQ ID NO: 1562 - protein, 6 aa, synthetic construct
LRSPHY

SEQ ID NO: 1563 - protein, 6 aa, synthetic construct
ITSPHL

SEQ ID NO: 1564 - protein, 6 aa, synthetic construct
GHSPHG

SEQ ID NO: 1565 - protein, 6 aa, synthetic construct
SKSPHS

SEQ ID NO: 1566 - protein, 6 aa, synthetic construct
KLSPHS

SEQ ID NO: 1567 - protein, 6 aa, synthetic construct
SPHIPR

SEQ ID NO: 1568 - protein, 6 aa, synthetic construct
SPHSGP

SEQ ID NO: 1569 - protein, 6 aa, synthetic construct
SPHRMN

SEQ ID NO: 1570 - protein, 6 aa, synthetic construct
SPHLRL

SEQ ID NO: 1571 - protein, 6 aa, synthetic construct
SPHLKG

SEQ ID NO: 1572 - protein, 6 aa, synthetic construct
SPHSRA

SEQ ID NO: 1573 - protein, 6 aa, synthetic construct
SSPHRH

SEQ ID NO: 1574 - protein, 6 aa, synthetic construct
LSPHKR

SEQ ID NO: 1575 - protein, 6 aa, synthetic construct
TSPHRH

SEQ ID NO: 1576 - protein, 6 aa, synthetic construct
GSPHYK

SEQ ID NO: 1577 - protein, 6 aa, synthetic construct
GSPHRT

SEQ ID NO: 1578 - protein, 6 aa, synthetic construct
TSPHTK

SEQ ID NO: 1579 - protein, 6 aa, synthetic construct
SSPHAR

SEQ ID NO: 1580 - protein, 6 aa, synthetic construct
LSPHRG

SEQ ID NO: 1581 - protein, 6 aa, synthetic construct
GSPHAR

SEQ ID NO: 1582 - protein, 6 aa, synthetic construct
SSPHMK

SEQ ID NO: 1583 - protein, 6 aa, synthetic construct
TSPHKP

SEQ ID NO: 1584 - protein, 6 aa, synthetic construct
ASPHRI

SEQ ID NO: 1585 - protein, 6 aa, synthetic construct
WSPHVK

SEQ ID NO: 1586 - protein, 6 aa, synthetic construct
LSPHGR

SEQ ID NO: 1587 - protein, 6 aa, synthetic construct
TSPHYR

SEQ ID NO: 1588 - protein, 6 aa, synthetic construct
RSPHSY

SEQ ID NO: 1589 - protein, 6 aa, synthetic construct
HSPHRG

SEQ ID NO: 1590 - protein, 6 aa, synthetic construct
GSPHSK

SEQ ID NO: 1591 - protein, 6 aa, synthetic construct
RSPHKF

SEQ ID NO: 1592 - protein, 6 aa, synthetic construct
MSPHHK

SEQ ID NO: 1593 - protein, 6 aa, synthetic construct
TSPHAR

SEQ ID NO: 1594 - protein, 6 aa, synthetic construct
ASPHSR

SEQ ID NO: 1595 - protein, 6 aa, synthetic construct
MSPHMR

SEQ ID NO: 1596 - protein, 6 aa, synthetic construct
SSPHYH

SEQ ID NO: 1597 - protein, 6 aa, synthetic construct
TSPHQR

SEQ ID NO: 1598 - protein, 6 aa, synthetic construct
ISPHAK

SEQ ID NO: 1599 - protein, 6 aa, synthetic construct
ISPHQR

SEQ ID NO: 1600 - protein, 6 aa, synthetic construct
QSPHVR

SEQ ID NO: 1601 - protein, 6 aa, synthetic construct
LSPHAR

SEQ ID NO: 1602 - protein, 6 aa, synthetic construct
LSPHRS

SEQ ID NO: 1603 - protein, 6 aa, synthetic construct
MSPHRH

SEQ ID NO: 1604 - protein, 6 aa, synthetic construct
VSPHKQ

SEQ ID NO: 1605 - protein, 6 aa, synthetic construct
LSPHTK

SEQ ID NO: 1606 - protein, 6 aa, synthetic construct
HSPHSR

SEQ ID NO: 1607 - protein, 6 aa, synthetic construct
NSPHGK

SEQ ID NO: 1608 - protein, 6 aa, synthetic construct
TSPHVR

SEQ ID NO: 1609 - protein, 6 aa, synthetic construct
LSPHLG

SEQ ID NO: 1610 - protein, 6 aa, synthetic construct
ESPHRP

SEQ ID NO: 1611 - protein, 6 aa, synthetic construct
RSPHDR

SEQ ID NO: 1612 - protein, 6 aa, synthetic construct
RSPHLN

SEQ ID NO: 1613 - protein, 6 aa, synthetic construct
RPSSPH

SEQ ID NO: 1614 - protein, 6 aa, synthetic construct
LHGSPH

SEQ ID NO: 1615 - protein, 6 aa, synthetic construct
RLGSPH

SEQ ID NO: 1616 - protein, 6 aa, synthetic construct
HYSSPH

SEQ ID NO: 1617 - protein, 6 aa, synthetic construct
RFGSPH

SEQ ID NO: 1618 - protein, 6 aa, synthetic construct
RSASPH

SEQ ID NO: 1619 - protein, 6 aa, synthetic construct
VRYSPH

SEQ ID NO: 1620 - protein, 6 aa, synthetic construct
KTASPH

SEQ ID NO: 1621 - protein, 6 aa, synthetic construct
VGSSPH

SEQ ID NO: 1622 - protein, 6 aa, synthetic construct
HRTSPH

SEQ ID NO: 1623 - protein, 6 aa, synthetic construct
TPRSPH

SEQ ID NO: 1624 - protein, 6 aa, synthetic construct
LRSSPH

SEQ ID NO: 1625 - protein, 6 aa, synthetic construct
LARSPH

SEQ ID NO: 1626 - protein, 6 aa, synthetic construct
YRASPH

SEQ ID NO: 1627 - protein, 6 aa, synthetic construct
RSGSPH

SEQ ID NO: 1628 - protein, 6 aa, synthetic construct
WGTSPH

SEQ ID NO: 1629 - protein, 6 aa, synthetic construct
RGSSPH

SEQ ID NO: 1630 - protein, 6 aa, synthetic construct
WHSSPH

SEQ ID NO: 1631 - protein, 6 aa, synthetic construct
SRGSPH

SEQ ID NO: 1632 - protein, 6 aa, synthetic construct
IQGSPH

SEQ ID NO: 1633 - protein, 6 aa, synthetic construct
RPGSPH

SEQ ID NO: 1634 - protein, 6 aa, synthetic construct
APASPH

SEQ ID NO: 1635 - protein, 6 aa, synthetic construct
RQGSPH

SEQ ID NO: 1636 - protein, 6 aa, synthetic construct
KTMSPH

SEQ ID NO: 1637 - protein, 6 aa, synthetic construct
HWSSPH

SEQ ID NO: 1638 - protein, 6 aa, synthetic construct
RYSSPH

SEQ ID NO: 1639 - protein, 6 aa, synthetic construct
RTGSPH

SEQ ID NO: 1640 - protein, 6 aa, synthetic construct
RNNSPH

SEQ ID NO: 1641 - protein, 6 aa, synthetic construct
APRSPH

SEQ ID NO: 1642 - protein, 6 aa, synthetic construct
LRASPH

SEQ ID NO: 1643 - protein, 6 aa, synthetic construct
PPGSPH

SEQ ID NO: 1644 - protein, 6 aa, synthetic construct
ARGSPH

SEQ ID NO: 1645 - protein, 6 aa, synthetic construct
VGGSPH

SEQ ID NO: 1646 - protein, 6 aa, synthetic construct
TGRSPH

SEQ ID NO: 1647 - protein, 6 aa, synthetic construct
WPNSPH

SEQ ID NO: 1648 - protein, 6 aa, synthetic construct
SWKSPH

SEQ ID NO: 1649 - protein, 6 aa, synthetic construct
RSLSPH

SEQ ID NO: 1650 - protein, 6 aa, synthetic construct
MKHSPH

SEQ ID NO: 1651 - protein, 6 aa, synthetic construct
RSYSPH

SEQ ID NO: 1652 - protein, 6 aa, synthetic construct
SYGSPH

SEQ ID NO: 1653 - protein, 6 aa, synthetic construct
RTFSPH

SEQ ID NO: 1654 - protein, 6 aa, synthetic construct
VTGSPH

SEQ ID NO: 1655 - protein, 6 aa, synthetic construct
RTHSPH

SEQ ID NO: 1656 - protein, 6 aa, synthetic construct
AQRSPH

SEQ ID NO: 1657 - protein, 6 aa, synthetic construct
GGRSPH

SEQ ID NO: 1658 - protein, 6 aa, synthetic construct
LWRSPH

SEQ ID NO: 1659 - protein, 6 aa, synthetic construct
SPHKYQ

SEQ ID NO: 1660 - protein, 6 aa, synthetic construct
NVKSPH

SEQ ID NO: 1661 - protein, 6 aa, synthetic construct
ISPHGR

SEQ ID NO: 1662 - protein, 6 aa, synthetic construct
SPHRTL

SEQ ID NO: 1663 - protein, 6 aa, synthetic construct
SPHRVV

SEQ ID NO: 1664 - protein, 6 aa, synthetic construct
SPHRAM

SEQ ID NO: 1665-4486 - skipped (2822 entries)

SEQ ID NO: 4487 - protein, 9 aa, synthetic construct
NGSGQNQQT

SEQ ID NO: 4488-4672 - skipped (185 entries)

SEQ ID NO: 4673 - DNA, 23 bp, synthetic construct
  source 1..23: mol_type = other DNA
acaaacaccattgtcacactcca

SEQ ID NO: 4674 - DNA, 71 bp, synthetic construct
  source 1..71: mol_type = other DNA
acaaacaccattgtcacactccacacaaacaccattgtcacactccacacaaacaccattgtcacactcca

SEQ ID NO: 4675 - DNA, 23 bp, synthetic construct
  source 1..23: mol_type = other DNA
tccataaagtaggaaacactaca

SEQ ID NO: 4676 - DNA, 22 bp, synthetic construct
  source 1..22: mol_type = other DNA
agtgaattctaccagtgccata

SEQ ID NO: 4677 - DNA, 24 bp, synthetic construct
  source 1..24: mol_type = other DNA
agtgtgagttctaccattgccaaa

SEQ ID NO: 4678 - DNA, 23 bp, synthetic construct
  source 1..23: mol_type = other DNA
agcaaaaatgtgctagtgccaaa

SEQ ID NO: 4679 - DNA, 22 bp, synthetic construct
  source 1..22: mol_type = other DNA
atacatacttctttacattcca

SEQ ID NO: 4680 - protein, 7 aa, synthetic construct
TLAVPFK

SEQ ID NO: 4681-4699 - skipped (19 entries)

SEQ ID NO: 4700 - protein, 4 aa, synthetic construct
SPHS

SEQ ID NO: 4701 - protein, 5 aa, synthetic construct
SPHSK

SEQ ID NO: 4702 - protein, 4 aa, synthetic construct
HDSP

SEQ ID NO: 4703 - protein, 5 aa, synthetic construct
HDSPH

SEQ ID NO: 4704-4735 - skipped (32 entries)

SEQ ID NO: 4736 - protein, 6 aa, synthetic construct
SPHAKA

SEQ ID NO: 4737-4739 - skipped (3 entries)

SEQ ID NO: 4740 - protein, 6 aa, synthetic construct
SPHKSL

SEQ ID NO: 4741-4742 - skipped (2 entries)

SEQ ID NO: 4743 - protein, 6 aa, synthetic construct
SPHKSW

SEQ ID NO: 4744-6403 - skipped (1660 entries)

SEQ ID NO: 6404 - protein, 27 aa, synthetic construct
KTINGSGQNQQTLKFSVAGPSNMAVQG

SEQ ID NO: 6405 - protein, 12 aa, synthetic construct
KTINGSGQNQQT